United States Patent Application Publication US 2012/0309003 A1 - sequence listing, part 5

SEQ ID NO: 924 - DNA, 13770 bp, Escherichia coli
atcctgtatcagtcctgcaaaatttcatgagtgccttattaactggatgcgtgactgccattcatcaaatgataaagacgtcattgcaattgatggaaaaacgctccggcactcttatgacaagagtcgccgcaggggagcgattcatgtcattagtgcgttctcaacaatgcacagtctggtcatcggacagatcaggacggatgagaaatctaatgagattacagctatcccagaacttcttaacatgctggatattaaaggaaaaatcatcacaactgatgcgatgggttgccagaaagatattgcagagaagatacaaaaacagggaggtgattatttattcgcggtaaaaggaaaccaggggcggctaaataaagcctttgaggaaaaatttccgctgaaagaattaaataatccagagcatgacagttacgcaatgagtgaaaagagtcacggcagagaagaaatccgtcttcatattgtttgcgatgtccctgatgaacttattgatttcacgtttgaatggaaaggactgaagaaattatgcgtggcagtctcctttcggtcaataatagcagaacaaaagaaagagccagaaatgacggtcagatattatatcagttctgctgatttaaccgcagaaaagttcgccacagcaatccgaaaccactggcacgtggagaataagctgcactggcgtctggacgtggtaatgaatgaagacgactgcaaaataagaagaggaaacgccgcagaattattttcagggatacggcacatcgctattaatattttgacgaatgataaggtattcaaggcagggttaagacgtaagatgcgaaaagcagctatggacagaaactatctggcgtcagtccttgcggagagcgggctttcgtagtcttaccccgactctcccccagccttaaacacaacccccactcaccgcaacctaaactcatccgcatcctgccatgccggaaacttttctctatattcccgcaatgccaccatcgacagctccgcatcaatgcgcgttgcctgatgcgcgtcggcagtagcgataatctcgccctgcgggttaatcacccggctgtcaccgcgataatggcagccgttgccatcgctgccgacgcgattgcatcccgccacatacgcctgattctcaatcgcgcgggccgtcagcaatgcctgccagtgcagagagcgcggagcaggccagttggcaacgtagatggcgaggtcataatcgttgagattgcgcgaccacaccggaaaacgtaagtcgtagcacaccaacggcaaaatacgccagccgcgccattccacaatcactcgcgcattgcccgctttataatgtagatgctcatctgccatgcggaacagatgacgcttatcataaaaatgtaccgtgccgcccggctcaaccagcaaaaagcggttaaccgaaccagactccgtttgtaatgcaacactgcctgcaatcagcgcattgcactgctgcgccttagctgtcatccagttcactacgtcatcttgtgctagcgacgaagctgccgcttccatggcaaagccgctggtaaacatctccggtagaacgatcacatcgcgcccggtaataccttccagttgacgatcaaaatgacgcaggttggcagggccatccatccacaccagtggttgctgcaaaagcgtaatcttcaaaccaggcacggtgtacaactcctttatgcgaagggttttataactttaacaccttatcaggcagttgccttagcgcagaataaattgataacaaatgctgatattggaaatatctgatttgcaaattatcgtgttatcggcaggctttagaaggttaataacatgggcaggataagctcgggaggaatgatgtttaaggcaataacgacagtcgccgctctggtcatcgccaccagtgcaatggcgcaggatgatttaaccattagcagccttgcaaagggcgaaaccaccaaagctgcatttaatcagatggtacaagggcataagctgcctgcctgggtgatgaaaggcggtacttatactcccgcacaaaccgtaacgttgggagatgagacgtatcaggtgatgagcgcgtgcaaaccgcatgactgtggctcgcaacgtatcgctgtgatgtggtccgagaaatctaatcagatgacggggctgttctcgactattgatgagaaaacgtcgcaagagaaactcacctggctgaatgtgaacgatgcgctttcgattgatggtaaaacggtgttgttcgcggcgttgaccggcagcctggaaaaccatccggatggctttaattttaaataattagcggataaagaaacggagcctttcggctccgttattcatttacgcggcttcaactttccgcactttctccggcaactttaccggcttcgtcgccagctcttccggatcaaagtcatcaacgttaatactgcgcagacggctttcttcagctttcaccagaatagcggcttcatctttatcaatcagccccttcgccagcgcgttgtgcgccagttcatccagacgggtaaacggcaggtttttacccagctctttacagatccgctgatgaattgggtcggcggcaatcacatccaccagcgcctcttccagcaagccaaccggattatgctcgctcggcgtcaggtactgaccgcgaccaatgcgggaacgggtggcgttcggcacttgtaaaatcttcgccactttatgatccagcttgtcagaaggtgccagataatgacgtccggtcgggaagatcaccacattcagcagcccggcaaccacgcggttcgggaagttttgcagtaaatcatccatcgcctgttcagcctgatacagcgcatcttgtacgccccagtgcaccagcggcaggtcggcttcattacggccttcgtcgtcataacgcttcagaacggcagaggcgaggtagagctggcttaaaatatcccccagacgggccgagatgcgctcgcgacgtttcaggctgccgcccagcactgccatcgagacatcagaaagcagggcgaggttggcgctcaggcggttcaggtgctgatagtagcgtttagtggcatcgccggttggcgtgctgctggttaaaccgcgcgtcaggcccagccagaagctgcgaactttgttgctaccgacgtgaccgatatgtttgaacaacagtttatcgaacgcgttgacgtcattgttcttcgccgcttccatctcttccagcacgtacggatggcaacgaatcgctccttgtccgaagatcatcatgctgcgggtcagaatgttagccccttcaacggtgatggcaatcggtgcgccctggtaagcacgcgccaggaagttgctttgcccgagcataatgcctttgccaccagtgatatccatcgcatcaataatcgactgctgcccgcggtgggtacagtgatacttaacgatagccgacagcacggcaggtttttcgccgagcataatgccgtaggtaatcagcgatgccgcagcatccatcacgtaggcattaccggcaatacgcgccagcggctcttcaatcccttccatcttaccgatagagattttgaactgacggcgaatgtgagcatacgcgcccgttgccagcgctaccgatttcacgccgccggttgagttggaaggcagggtgatgccgcggcctaccgagaggcactccaccagcatccgccagccttgcccggccattttcggccccccgatgatgtaatcgatcggtacgaagacatctttaccgcgcgtcggtccgttctggaacggtacgttcagcgggaagtggcgacgaccaatttccacgcccggcgtggtggtcgggatcagcgcacaggtaatacctaaatcttctgcgccacccagcagcttttccgggtcggagagtttaaacgccagcccaagcacagtcgcaatcggtgccagcgtaatatagcgtttgttccaggtcagacgcatccccagcacctgctggccctgccattcgcccatgcagacaatcccggtgtccggaatcgcgcccgcatcggaacccgcttccgggcttgtcagtgcaaagcaagggatctcctgaccacgcgccagacgcggcagatagtgatctttctgctcgtcagtgccgtaatgttgcagcagctcgcccgggcctaatgagttcggcacgccgacggtaatcgccaggatcccgctcacgccggagagtttttgcagcacgcgagactgggcataagctgagaactccagtccgccgtactcttttttgataatcatcgcgaagaagcgatgctctttaaggtacgcccacaactccggcggcagatccgccagctcatgagtaatctggaaatcattcgccatccggcaggcttcttctaccgggccgtcgagaaacgcttgctcttcggcggtcaggcgcggctgcggatagttatgcagctttttccagtccggcttgccctggaacaagtcgccctcccaccaggtggtgcccgcatcaatcgcttctttctcagtgcgcgacatcggcggcatcaccttacggaaaccgcgaaataccggcgcggaaatcatcgacttacgcataggcgcaaagttaaatggcacgaggataatggccagaggcaccagtacccacgccgaccacagaccagcaacgccgagggcggctgtccaggcgagcaaaatcagactgctgataaataagctcacgcggtgatagaacaacgcgccgagcaggacaaccgtagcgagaatactcaaaatcatcataacgaaaagccccttacttgtaggaggtctgaccacttgtgatgatatggttgtagtggatgtaaaaacatttagcaatgtgtttacaatataattacaacaaagctcacattgttgctgtttttatccgcacttcaggtcaaaaagtcctggtcatagcacctgcccgtacttctcgcttttggcggtatccggtacactgcattttgtctattacatttatgctgaaggatatcctcatgtaccaggatcttattcgtaacgaactgaacgaagcggcggaaacgctggctaactttttaaaagatgacgccaatattcacgccattcagcgcgcggcggtcctgttagcagacagctttaaagccggtggcaaagtgctttcctgcggcaacggcggttcccattgcgacgctatgcactttgccgaagagttgaccggtcgctaccgtgaaaaccgtccgggctacccggcgattgctatttctgacgttagtcatatttcctgcgtcggtaatgatttcggtttcaatgatattttctcccgctacgttgaagcggtaggtcgcgaaggcgatgtactgctggggatctccacctccggtaactctgcaaacgtgatcaaagcgatcgcagcggcgcgtgagaaggggatgaaagtgatcaccctgaccggtaaagacggcggtaaaatggctggcacggcggatatcgaaattcgcgttccgcactttggttatgccgaccgcattcaggagattcacattaaagtgatccatatcctgatccagttaattgaaaaagagatggttaagtaagtctggcgtaggccggataaggcgtttacgccgcatccggcacttgtgcgctgatgcctgatgcgatgctgacgcgtcttatcatgcctacaaatctgtacgcgaaccgtaggccgaataattcgtttacgccgcatccgacctgaaaattcttaaatcaatcttcgccgggggccatgcgctcccgctgttgtggaggttacccatgtgcgaattgctcgggatgagcgccaacgtccctaccgatatctgctttagtttcaccggacttgtacagcgtggtggtggaaccgggccacataaagatggctggggcattaccttttacgaaggtaaaggctgtcgcacatttaaagatccacaacccagctttaattcccccatcgccaaacttgtccaggactacccgataaaatcctgttcggtggtggctcatattcgccaggctaatcggggcgaggtggcgctggaaaatactcacccatttacccgcgagttatgggggcgtaactggacttatgcccataacggacaactgacgggctacaaatcactggaaaccggcaacttccgcccggtcggtgaaaccgatagcgaaaaagccttctgctggctcctgcataaattaacgcagcgttacccgcgcacaccgggcaacatggcggcagtgtttaaatatatcgcctcactggcggatgaactgcggcagaagggcgttttcaacatgctgctttctgacgggcgctatgtgatggcgtattgctcgactaatttacactggatcacccgccgcgcgccgtttggcgtggcaacgctgctggatcaggatgtggaaatcgacttcagctcgcagaccacaccgaatgatgtggtcacggtgattgcaacacagccgctgacgggcaatgaaacctggcaaaagattatgccaggcgaatggcgcttattttgcctcggggagcgtgtagtttgatgccagttgtggctgcacaacttcgtggcttaacggcttgctgaccacgtaacgaccattgaccacagaaacggtcggtggcttacgggtttgctcaaagtagtcgtaacccggcttcagttgctcccagaagtccttaaagttggaatatttatggcgcttcatattggcgtcggtcatgcggaacgggtaaatactcacctgcacgctcggctgaccaaacaccagcgcaccagtaacgaactggaagatctcatcaataccctgattggtcattgcgtagcagccgatggaaacacaatcgccgtggatcatcaggtatttcccttcataaccatgcgcacggtcataggcattggggaaaccaatattaatcgctttgtagtaacggctgtctggttttaactgattacgctggacgctataaaacccttccgggcttttgaaatcgccctgacgctgttttggccctaagccgccggaatatttacagattttataactgtcgagcagctgatattgctcgcccattttgacgtagagatcgagcgtacgttcttccttgaagatctggatgtagacaggggatcccatcaactgctgcttatactctttgctcactggcgtggtcgagctactgctgcccagcaaaccggcaaacgaaacgcacgggatcaacaacatcgcaagaattaatgcgattttacgcatactgcttattccttgataaaacggttacacacgccaggacggcaaaatagatcccaaatcggaatagtctggatttggaaggctcacattatcaccaaaagagttttacgcaagcctgtcggcgcagggtttacaaatttcatcggcagcgtgctttacccaaagagcgccgcgtgagttccagttctctcaaatcgtaaaagtttatcggtaagtttgtaaatcaggatccagtccggttcgacatgagcatcgcgataacctttccatgaaccttgcagcgggtggtctttataaacagctggaagcggtaaagcattattgataagaagcctcataagatatttcaatttattcatatccttatgacgcttttgtgcaagttttacatcctttgaaaattgtcccgagtattcaatatccctttgaatcatatttaaattcctaatttatcaaataaatcatcggcgtctttggccttatgaacatcaacgccagcttcgctgtttttgattgattgaatggttaattgattaggctcgcgtaaatcaaacggcaatgccttttcacgcgcgacctttgtgagggttatgcgaaccaggtcagagatggtcagccccatcccggccagtacgtccgccgcctgattcttcagatcttcatcgattcgggcgcgaacaaatgcgttagcagccattggggtatctcctgtgctgtatatttattcagcttgaattgtagctcaaatgagcaacagcgacaatccatgagtaatttaataaacggatgtttttacataattaactgaaatatatttattaattttataataatggtttattaagtttgttcaggtacgggccgggatacactgcaacatcaatgcatgatcagccattattgagtatgtccttgccgtcgattccctcttttgtgttgtcgggattactgttgctttgcttgccgttttcttcatttgccagcgccaccacatcacatatcactttcagctacgccgcccgccagcggatgcaaaatcgtgcgcgtttattaaaacagtaccaaacccatctgaaaaaacaggccagctatattgtggaaggcaatgccgaaagcagaagggcgctacgccagcacaaccgcgaacagataaaacagcatccagaatggtttcctgcgccgctcaaggcgagtgacagacgctggcaggcgctggcggaaaacaaccatttcttaagcagcgaccatctgcataacatcaccgaagtagcgattcaccgtctggagcaacagcttggcaagccttacgtctggggcggtacgcggcccgatcaaggcttcgactgtagcgggttagttttttatgcctacaacaagatccttgaggcgaagctcccacgcacggccaacgagatgtatcactaccatcgggcaacgattgtggcgaataacgacctgcgccggggagatttgctatttttccatatccacagccgcgagattgccgaccatatgggggtgtatctgggcgacggtcagtttattgagtcaccgcgcaccggggaaaccattcgggtaagtcggttagctgaacctttctggcaggatcactttttaggcgcgcggcggatattgacggaagagacgattttgtaaatgggtaatattgacgaactggcaaaaggtcggatgccacgcggcatccgacctgtttacatctgggctgaaaactcacgttctaagacatcaacaatgagctggttttttgaaatggaatgttgtctggcgacgatggtcagccgcgaatcaatgtgatgaggaacacgaagcgtcaggcgtttttgctcttcttcttcacgaaaaggggcaataccgtcctcttcacaatccgccatccactcatccagcgcgctttcgccttcacgatataatgcctcaatacttatggctacaaagtcacaataaccgtttacattgaggaacttgccgcgaaatgcgttgatatcggcttcaaatgtcactgcggctggttgacctttaattgtgataatgttcgatgctttattcataatctacccctacacagttaacaaaccactccttaagacctgctactgcgcctttatccatcacattctttggatgtggctcatgtgtgctgaatttggtcgttccaatctgaaattttcgtctggagccgttgttattttttattgttccacccaaagctttaatgagtgcaacaacatcatcccatttaattccagattttggcggctccgtcattacatcgtcgaatgtttttctatgacgagaacctagcgcgctgaccttaatcatactatcaatccatgacgtcattgtatggtgtcatcgtagtctctttgcagtgtgacgtcaattaatggtgtcaggtgctgcaaagcatggaaaagaatcccccatcaactcaacgcccccataatcttcaactccagctcatccggcacttcgttatacgacagcacatgcagccccggcgcaaacaaccttgcataacgcgccagcaaagggcgcagctgcggtggcaccagcagcaccgggtctttccccgccgctttcatctgctctttcacctgtggcatcgtactctggaactggttgagcatattcgggtccactggcacgctgtcgagcatcactttaccgccctgttgcgcctgattcactaggttagtcagcagattttccagctcattattcagggtatacaccgtcagctcctgcttgcgaacgaacggatgggtaatgctgcgccgcagcgccaggcgcacatcggctgccagcagaatatgatctttggtcaccgcgctactggcgaccagcacggtggcgatggtgacgatatcgcgcagggaaacgccttcggtcagcaacgcccggtacactttcagcaactggctgtaattgagcgccgcgcttaagtcttccgccaggcgcggggccatcgacgacaggcggttatgcagttgcgtaatgtcatcatagttaaacaaatcaggaatatagctgcgcacaatcttgtttacatgggtggcaattacgctggcgctgtcgatcacctgataacccatattcagcgccttcgctttctgcgcaggctggatccaggtcaccggcatcccgtacgccgggtcgttccccaatacgccgtcaatctcgccgtaggtttcgctggagggcagggccatcagtttatccgccggaatatccgcttcatcagcctttatgccgttgatgaaaatggcgtactggctgggcttgaggcggaagttttcccgaatgcggatctccggcaacaatacgccgttgccgtcagaaatcacctgccgcacgccgcgaatccgctgggtgagcgggttaccctgcgctttatcgaccagtgccaccagcttgtagccgaggcttaaactgataggctcgatcagcggtattgtctcccaactgacttgttgctcgctggtttcagtgatggtgcgggtcagcgtttcgaggcttttctcttccgcctctgccgcctgcgggcgtttgctcatccgccagccggtaaagccaagcagggcgctgaacagcaaaaacggcagatgcggcatccccggcaccaccgccagcacaaacataattccggcggcggtgtagagcaccgacgggcttgccagcagctggttacgcacatcatgggcgatatcgccgttgtcgctgacgcgggtgacgataatcgccgccgccgtggagagcagcagggaagggatctgcgccaccagaccgtcgccgatggtcatcagcacatattgctggaaggcggcatcggcgctcaggttgtatttgaagatcccgatacagacgccgccgatcaggttgatcgccagaatcatcatcccggcgatggcgtccccgcgcacaaacttcgacgccccgtccattgcgccgtagaaatcggcctcgctggcaacatctttacgccgggtttgcgcctgcgcctggttgatcaacccggcgttaagatcggcgtcaatcgccatctgcttgccgggcatcgcgtccagggtaaagcgggcagaaacctcggaaatacgctcggcccctttggtgacgacgataaagttgattgtcaacagcgtcagtaaatccgagcgtgaaagcattatcgccgcgctgcacgggcagtcgatttttaacggtggtggctgtcgccgttaaataaaatcagcccgtctcatccgccaaaacctgccaccgtggcggtgccggaagagacggagaaaaaagcgcgtgacgtcaatgagaaaacggtgctgctgaagaagaaatccgccaccgagcttggcgagctggcaaccagtatcaacaccattgcccgtgatgcgcatatggaagcgaatctggagatggagattgtcccgcagggattacgcgtgctgattaaagacgaccagaatcgcaatatgttcgaacgcggcagcgcgcagattatgccgttctttaaaaggctgctggtggagctcgcgccagttttcgactcgctcgataacaaaattattattaccgggcataccgatgcgatggcctacaaaaacaatatctacaacaactggaacctttcgggcgatcgcgcgctttcagctcgtcgggtgctggaagaggccggaatgccggaagataaagtgatgcaggtaagcgcaatggcggaccagatgctgctggacgcgaaaaatccgcaaagcgcgggcaaccggcgcattgagattatggtgctgaccaaaagtgcgtccgatacgctgtatcaatactttggtcagcatggggataaagtggtgcagccgctggtgcaaaagctggataagcagcaggtgctttcacagcgaacgcgctagatgctgaatctttacgcatttctcaaaccctgaaatcactgtatactttaccagtgttgagaggtgagcaatgcgtaaaatcattcatgtggatatggactgctttttcgcagcggtggagatgcgcgacaatcccgccctgcgcgatatccctattgctattggcggcagccgcgaacgtcggggggtgatcagcaccgccaattatcccgcgcgtaaatttggcgtacgtagcgctatgccgacagggatggcgctcaaattatgcccgcatctcaccttgcttccggggcgctttgacgcctacaaagaagcctcaaatcatattcgcgaaattttctcgcgctacacctcgcgcattgaaccgttgtcactggatgaagcctatctcgatgtcaccgatagcgtccattgccacggttctgcgactctcatcgcccaggaaatccgccagacgattttcaacgagctgcaactgacggcatctgcgggcgtggcaccagtaaagtttctcgccaaaattgcctccgacatgaataaacccaacggtcagtttgtgattacgccggcagaagttccggcatttttacaaaccttaccactggcaaaaatccccggcgtcggcaaagtctcggcggcaaaactggaagcgatggggctacgaacctgcggtgatgtacaaaagtgtgatctggtgatgctgcttaaacgctttggcaaatttggccgcattttgtgggagcgtagtcaggggattgacgagcgcgacgttaacagcgaacggttgcgaaaatccgtcggcgtggaacgcacgatggcggaagatatccaccactggtctgaatgtgaagcgattatcgagcggctgtatccggaacttgaacgccgtctggcaaaggtgaaacctgatttactgattgctcgccagggggtgaaattaaagttcgacgattttcagcaaaccactcaggagcacgtctggccgcggctgaataaagctgacttaatcgccaccgcgcgtaaaacctgggatgaacgccgcggcgggcgcggtgtgcgactggtggggctgcatgtgacgttgcttgacccgcaaatggaaagacaactggtgctgggattatgaataacatacaaataagagactatcagcctggcgattttcagcaactatgcgctattttcattagagcggttacgatgactgccagtcagcattattcaccacaacaaattgccgcctgggcgcagattgacgaatctcgctggaaggagaaactcgcgaaatcacaagtgcgggttgcagtcattaatgcaaaactggtcggctttattacctgcgttgaacactatatcgatatgttatttgttgaccctgaatacacccgccgtggggttgccagcgctttgttaaaacctttgattaagtctgaatccgaacttacggtggacgcaagcataaccgcaaaacccttttttgaacgttatggttttcagacagtttaagcagcaacgcgttgaatgt

SEQ ID NO: 925 - DNA, 908 bp, Escherichia coli
ttttcggttagatggtaccctgccattcgcattgtcattcgctgctttaactgccttcggtgtcgcggcaagcgtttcagatgtgctgttggttgcactgctgagctgtactatccctttttcgtcgtgctcgcatcctcaagcgccacggcggatgcaatatcctctgcccgttttgccgctgtctcggcgcgcgttgccgcggattccgccgtacttttgctctgagctgccgccgtcgcactgccagcagcctctgtcgccttcgtggatgccgtcgcggcgctgcccttcgctgctgacgcctgtctggtcgcctcatcttttgaagcagacgcagatgatgccgatgacgccgccgaactggcggacgatgcggcagccgtttttgaggattctgcgctggtttccgaggctttcgcgttcgtttcggatgtcttcgctgcctcttttgaggccgccgcatcccgtgctgaagtggcagcttctgacgccttcgtggtcgcggtggatgcagaagtggctgccgattgttgtgacgcagccgcattcgtttctgacgttttcgccgcaccggcactggtagccaccgcgctttttgaggactctgcagcggcagcatctttttgatgcttcagtagcctttgttgatgccgttcctgcgctggaagacgctgactgagccgacgtcgcggcctgcccggctgatgtgctggctgcgcgtgctgagcctgcagcatcagtcgcatgggttgccgcctcactggcagatatgctggcatcgctggctgacttcttcgcggctgccgtgttctgtgccaccgcggacgcgttacgtgacacctcttccaccatctagctgcaaagcggcgcagtgcctccggtcggacatcatcctccgtcatggc

SEQ ID NO: 926 - DNA, 441 bp, Escherichia coli
agtcccgcctgattgccggaaaggaccagcgttttgttgaaatcggacagggttgagttgccctgataccaggcatacgccagcgcaccggtcgccaccgccagcgaggtagcccccaccatcggcagggtgatcgcaccggcaagccccctgaacatggggatcatcccgccgaaggagtccttaacctgaccaccctgttgcagcaggatcagccacggactttgcccgcctgcaagctgcgtggccacgtcggtgaactgtgcaggcagcatacgcatggcggctttatactgcccgacggaaatccccgctttctgtgcagccagcgcctgtcggctcagcgactgttcaacgactgccgctgttttttcgcatcactttccgtaccggaaaaatgacgcctgactctggccatctgctcgtcaaatctggccgcat

SEQ ID NO: 927 - DNA, 256 bp, Escherichia coli
agtcggtgatcgcgtgtgtcagaccgcaaagcggcgaactgtctgcatggcgaagcgtccttcagaccgatataagcagcaataccgcagatgttttctctccgatacccgggatgctttccagcagtttcctgcggtgtttcatatccggatcatcgtctgtcaggtctttatctgcttctcaagacgcttcagctctgcttcaagccacagaaggtgagcatcaatgctcggtctctggacttcccgcgccgtt
